United States Patent Application Publication US 2018/0236103 A1 - sequence listing, part 6

SEQ ID NO: 140807 - RNA, 19 nt, Artificial Sequence
  Synthetic
  misc_feature (3)..(3): n is a, c, g, or u
uunacuuucucgccaacuu

SEQ ID NO: 140808 - RNA, 20 nt, Artificial Sequence
  Synthetic
  misc_feature (4)..(4): n is a, c, g, or u
uuunacuuucucgccaacuu

SEQ ID NO: 140809 - RNA, 21 nt, Artificial Sequence
  Synthetic
  misc_feature (5)..(5): n is a, c, g, or u
cuuunacuuucucgccaacuu

SEQ ID NO: 140810 - RNA, 22 nt, Artificial Sequence
  Synthetic
  misc_feature (6)..(6): n is a, c, g, or u
gcuuunacuuucucgccaacuu

SEQ ID NO: 140811 - RNA, 23 nt, Artificial Sequence
  Synthetic
  misc_feature (7)..(7): n is a, c, g, or u
ggcuuunacuuucucgccaacuu

SEQ ID NO: 140812 - RNA, 24 nt, Artificial Sequence
  Synthetic
  misc_feature (8)..(8): n is a, c, g, or u
aggcuuunacuuucucgccaacuu

SEQ ID NO: 140813 - RNA, 18 nt, Artificial Sequence
  Synthetic
ccuaucuuaucaacacuu

SEQ ID NO: 140814 - RNA, 19 nt, Artificial Sequence
  Synthetic
cccuaucuuaucaacacuu

SEQ ID NO: 140815 - RNA, 20 nt, Artificial Sequence
  Synthetic
ccccuaucuuaucaacacuu

SEQ ID NO: 140816 - RNA, 21 nt, Artificial Sequence
  Synthetic
gccccuaucuuaucaacacuu

SEQ ID NO: 140817 - RNA, 22 nt, Artificial Sequence
  Synthetic
ugccccuaucuuaucaacacuu

SEQ ID NO: 140818 - RNA, 23 nt, Artificial Sequence
  Synthetic
augccccuaucuuaucaacacuu

SEQ ID NO: 140819 - RNA, 24 nt, Artificial Sequence
  Synthetic
aaugccccuaucuuaucaacacuu

SEQ ID NO: 140820 - RNA, 18 nt, Artificial Sequence
  Synthetic
cgaccuugaggccuacuu

SEQ ID NO: 140821 - RNA, 19 nt, Artificial Sequence
  Synthetic
ccgaccuugaggccuacuu

SEQ ID NO: 140822 - RNA, 20 nt, Artificial Sequence
  Synthetic
accgaccuugaggccuacuu

SEQ ID NO: 140823 - RNA, 21 nt, Artificial Sequence
  Synthetic
gaccgaccuugaggccuacuu

SEQ ID NO: 140824 - RNA, 22 nt, Artificial Sequence
  Synthetic
cgaccgaccuugaggccuacuu

SEQ ID NO: 140825 - RNA, 23 nt, Artificial Sequence
  Synthetic
acgaccgaccuugaggccuacuu

SEQ ID NO: 140826 - RNA, 24 nt, Artificial Sequence
  Synthetic
aacgaccgaccuugaggccuacuu

SEQ ID NO: 140827 - RNA, 18 nt, Artificial Sequence
  Synthetic
  misc_feature (5)..(5): n is a, c, g, or u
auaunucuugccuuacuu

SEQ ID NO: 140828 - RNA, 19 nt, Artificial Sequence
  Synthetic
  misc_feature (6)..(6): n is a, c, g, or u
cauaunucuugccuuacuu

SEQ ID NO: 140829 - RNA, 20 nt, Artificial Sequence
  Synthetic
  misc_feature (7)..(7): n is a, c, g, or u
ucauaunucuugccuuacuu

SEQ ID NO: 140830 - RNA, 21 nt, Artificial Sequence
  Synthetic
  misc_feature (8)..(8): n is a, c, g, or u
uucauaunucuugccuuacuu

SEQ ID NO: 140831 - RNA, 22 nt, Artificial Sequence
  Synthetic
  misc_feature (9)..(9): n is a, c, g, or u
uuucauaunucuugccuuacuu

SEQ ID NO: 140832 - RNA, 23 nt, Artificial Sequence
  Synthetic
  misc_feature (10)..(10): n is a, c, g, or u
guuucauaunucuugccuuacuu

SEQ ID NO: 140833 - RNA, 24 nt, Artificial Sequence
  Synthetic
  misc_feature (11)..(11): n is a, c, g, or u
gguuucauaunucuugccuuacuu

SEQ ID NO: 140834 - RNA, 18 nt, Artificial Sequence
  Synthetic
gcgcaugcguggaaccuu

SEQ ID NO: 140835 - RNA, 19 nt, Artificial Sequence
  Synthetic
agcgcaugcguggaaccuu

SEQ ID NO: 140836 - RNA, 20 nt, Artificial Sequence
  Synthetic
cagcgcaugcguggaaccuu

SEQ ID NO: 140837 - RNA, 21 nt, Artificial Sequence
  Synthetic
ucagcgcaugcguggaaccuu

SEQ ID NO: 140838 - RNA, 22 nt, Artificial Sequence
  Synthetic
aucagcgcaugcguggaaccuu

SEQ ID NO: 140839 - RNA, 23 nt, Artificial Sequence
  Synthetic
caucagcgcaugcguggaaccuu

SEQ ID NO: 140840 - RNA, 24 nt, Artificial Sequence
  Synthetic
ccaucagcgcaugcguggaaccuu

SEQ ID NO: 140841 - RNA, 18 nt, Artificial Sequence
  Synthetic
gcauggacauugacccuu

SEQ ID NO: 140842 - RNA, 19 nt, Artificial Sequence
  Synthetic
ggcauggacauugacccuu

SEQ ID NO: 140843 - RNA, 20 nt, Artificial Sequence
  Synthetic
gggcauggacauugacccuu

SEQ ID NO: 140844 - RNA, 21 nt, Artificial Sequence
  Synthetic
ggggcauggacauugacccuu

SEQ ID NO: 140845 - RNA, 22 nt, Artificial Sequence
  Synthetic
uggggcauggacauugacccuu

SEQ ID NO: 140846 - RNA, 23 nt, Artificial Sequence
  Synthetic
uuggggcauggacauugacccuu

SEQ ID NO: 140847 - RNA, 24 nt, Artificial Sequence
  Synthetic
uuuggggcauggacauugacccuu

SEQ ID NO: 140848 - RNA, 18 nt, Artificial Sequence
  Synthetic
gccaacuuacaaggccuu

SEQ ID NO: 140849 - RNA, 19 nt, Artificial Sequence
  Synthetic
cgccaacuuacaaggccuu

SEQ ID NO: 140850 - RNA, 20 nt, Artificial Sequence
  Synthetic
ucgccaacuuacaaggccuu

SEQ ID NO: 140851 - RNA, 21 nt, Artificial Sequence
  Synthetic
cucgccaacuuacaaggccuu

SEQ ID NO: 140852 - RNA, 22 nt, Artificial Sequence
  Synthetic
ucucgccaacuuacaaggccuu

SEQ ID NO: 140853 - RNA, 23 nt, Artificial Sequence
  Synthetic
uucucgccaacuuacaaggccuu

SEQ ID NO: 140854 - RNA, 24 nt, Artificial Sequence
  Synthetic
uuucucgccaacuuacaaggccuu

SEQ ID NO: 140855 - RNA, 18 nt, Artificial Sequence
  Synthetic
  misc_feature (12)..(12): n is a, c, g, or u
cugugccuuggnuggcuu

SEQ ID NO: 140856 - RNA, 19 nt, Artificial Sequence
  Synthetic
  misc_feature (13)..(13): n is a, c, g, or u
gcugugccuuggnuggcuu

SEQ ID NO: 140857 - RNA, 20 nt, Artificial Sequence
  Synthetic
  misc_feature (14)..(14): n is a, c, g, or u
agcugugccuuggnuggcuu

SEQ ID NO: 140858 - RNA, 21 nt, Artificial Sequence
  Synthetic
  misc_feature (15)..(15): n is a, c, g, or u
aagcugugccuuggnuggcuu

SEQ ID NO: 140859 - RNA, 22 nt, Artificial Sequence
  Synthetic
  misc_feature (16)..(16): n is a, c, g, or u
caagcugugccuuggnuggcuu

SEQ ID NO: 140860 - RNA, 23 nt, Artificial Sequence
  Synthetic
  misc_feature (17)..(17): n is a, c, g, or u
ccaagcugugccuuggnuggcuu

SEQ ID NO: 140861 - RNA, 24 nt, Artificial Sequence
  Synthetic
  misc_feature (18)..(18): n is a, c, g, or u
uccaagcugugccuuggnuggcuu

SEQ ID NO: 140862 - RNA, 18 nt, Artificial Sequence
  Synthetic
  misc_feature (15)..(15): n is a, c, g, or u
acugccaacuggauncuu

SEQ ID NO: 140863 - RNA, 19 nt, Artificial Sequence
  Synthetic
  misc_feature (16)..(16): n is a, c, g, or u
uacugccaacuggauncuu

SEQ ID NO: 140864 - RNA, 20 nt, Artificial Sequence
  Synthetic
  misc_feature (17)..(17): n is a, c, g, or u
guacugccaacuggauncuu

SEQ ID NO: 140865 - RNA, 21 nt, Artificial Sequence
  Synthetic
  misc_feature (18)..(18): n is a, c, g, or u
uguacugccaacuggauncuu

SEQ ID NO: 140866 - RNA, 22 nt, Artificial Sequence
  Synthetic
  misc_feature (1)..(1): n is a, c, g, or u
  misc_feature (19)..(19): n is a, c, g, or u
nuguacugccaacuggauncuu

SEQ ID NO: 140867 - RNA, 23 nt, Artificial Sequence
  Synthetic
  misc_feature (2)..(2): n is a, c, g, or u
  misc_feature (20)..(20): n is a, c, g, or u
gnuguacugccaacuggauncuu

SEQ ID NO: 140868 - RNA, 24 nt, Artificial Sequence
  Synthetic
  misc_feature (3)..(3): n is a, c, g, or u
  misc_feature (21)..(21): n is a, c, g, or u
ggnuguacugccaacuggauncuu

SEQ ID NO: 140869 - RNA, 18 nt, Artificial Sequence
  Synthetic
accaaaugccccuaucuu

SEQ ID NO: 140870 - RNA, 19 nt, Artificial Sequence
  Synthetic
caccaaaugccccuaucuu

SEQ ID NO: 140871 - RNA, 20 nt, Artificial Sequence
  Synthetic
ccaccaaaugccccuaucuu

SEQ ID NO: 140872 - RNA, 21 nt, Artificial Sequence
  Synthetic
accaccaaaugccccuaucuu

SEQ ID NO: 140873 - RNA, 22 nt, Artificial Sequence
  Synthetic
gaccaccaaaugccccuaucuu

SEQ ID NO: 140874 - RNA, 23 nt, Artificial Sequence
  Synthetic
agaccaccaaaugccccuaucuu

SEQ ID NO: 140875 - RNA, 24 nt, Artificial Sequence
  Synthetic
uagaccaccaaaugccccuaucuu

SEQ ID NO: 140876 - RNA, 18 nt, Artificial Sequence
  Synthetic
cauuauuuacauacucuu

SEQ ID NO: 140877 - RNA, 19 nt, Artificial Sequence
  Synthetic
acauuauuuacauacucuu

SEQ ID NO: 140878 - RNA, 20 nt, Artificial Sequence
  Synthetic
gacauuauuuacauacucuu

SEQ ID NO: 140879 - RNA, 21 nt, Artificial Sequence
  Synthetic
  misc_feature (1)..(1): n is a, c, g, or u
ngacauuauuuacauacucuu

SEQ ID NO: 140880 - RNA, 22 nt, Artificial Sequence
  Synthetic
  misc_feature (2)..(2): n is a, c, g, or u
cngacauuauuuacauacucuu

SEQ ID NO: 140881 - RNA, 23 nt, Artificial Sequence
  Synthetic
  misc_feature (3)..(3): n is a, c, g, or u
ccngacauuauuuacauacucuu

SEQ ID NO: 140882 - RNA, 24 nt, Artificial Sequence
  Synthetic
  misc_feature (4)..(4): n is a, c, g, or u
accngacauuauuuacauacucuu

SEQ ID NO: 140883 - RNA, 18 nt, Artificial Sequence
  Synthetic
  misc_feature (5)..(5): n is a, c, g, or u
uuganuauuuggucucuu

SEQ ID NO: 140884 - RNA, 19 nt, Artificial Sequence
  Synthetic
  misc_feature (6)..(6): n is a, c, g, or u
cuuganuauuuggucucuu

SEQ ID NO: 140885 - RNA, 20 nt, Artificial Sequence
  Synthetic
  misc_feature (1)..(1): n is a, c, g, or u
  misc_feature (7)..(7): n is a, c, g, or u
ncuuganuauuuggucucuu

SEQ ID NO: 140886 - RNA, 21 nt, Artificial Sequence
  Synthetic
  misc_feature (2)..(2): n is a, c, g, or u
  misc_feature (8)..(8): n is a, c, g, or u
uncuuganuauuuggucucuu

SEQ ID NO: 140887 - RNA, 22 nt, Artificial Sequence
  Synthetic
  misc_feature (3)..(3): n is a, c, g, or u
  misc_feature (9)..(9): n is a, c, g, or u
guncuuganuauuuggucucuu

SEQ ID NO: 140888 - RNA, 23 nt, Artificial Sequence
  Synthetic
  misc_feature (4)..(4): n is a, c, g, or u
  misc_feature (10)..(10): n is a, c, g, or u
uguncuuganuauuuggucucuu

SEQ ID NO: 140889 - RNA, 24 nt, Artificial Sequence
  Synthetic
  misc_feature (5)..(5): n is a, c, g, or u
  misc_feature (11)..(11): n is a, c, g, or u
cuguncuuganuauuuggucucuu

SEQ ID NO: 140890 - RNA, 18 nt, Artificial Sequence
  Synthetic
  misc_feature (6)..(6): n is a, c, g, or u
caaagnauugugggucuu

SEQ ID NO: 140891 - RNA, 19 nt, Artificial Sequence
  Synthetic
  misc_feature (7)..(7): n is a, c, g, or u
ucaaagnauugugggucuu

SEQ ID NO: 140892 - RNA, 20 nt, Artificial Sequence
  Synthetic
  misc_feature (8)..(8): n is a, c, g, or u
gucaaagnauugugggucuu

SEQ ID NO: 140893 - RNA, 21 nt, Artificial Sequence
  Synthetic
  misc_feature (9)..(9): n is a, c, g, or u
ugucaaagnauugugggucuu

SEQ ID NO: 140894 - RNA, 22 nt, Artificial Sequence
  Synthetic
  misc_feature (10)..(10): n is a, c, g, or u
augucaaagnauugugggucuu

SEQ ID NO: 140895 - RNA, 23 nt, Artificial Sequence
  Synthetic
  misc_feature (11)..(11): n is a, c, g, or u
uaugucaaagnauugugggucuu

SEQ ID NO: 140896 - RNA, 24 nt, Artificial Sequence
  Synthetic
  misc_feature (12)..(12): n is a, c, g, or u
guaugucaaagnauugugggucuu

SEQ ID NO: 140897 - RNA, 18 nt, Artificial Sequence
  Synthetic
gcgggucaccauauucuu

SEQ ID NO: 140898 - RNA, 19 nt, Artificial Sequence
  Synthetic
ugcgggucaccauauucuu

SEQ ID NO: 140899 - RNA, 20 nt, Artificial Sequence
  Synthetic
uugcgggucaccauauucuu

SEQ ID NO: 140900 - RNA, 21 nt, Artificial Sequence
  Synthetic
uuugcgggucaccauauucuu

SEQ ID NO: 140901 - RNA, 22 nt, Artificial Sequence
  Synthetic
uuuugcgggucaccauauucuu

SEQ ID NO: 140902 - RNA, 23 nt, Artificial Sequence
  Synthetic
auuuugcgggucaccauauucuu

SEQ ID NO: 140903 - RNA, 24 nt, Artificial Sequence
  Synthetic
cauuuugcgggucaccauauucuu

SEQ ID NO: 140904 - RNA, 18 nt, Artificial Sequence
  Synthetic
acaggcgggguuuuucuu

SEQ ID NO: 140905 - RNA, 19 nt, Artificial Sequence
  Synthetic
uacaggcgggguuuuucuu

SEQ ID NO: 140906 - RNA, 20 nt, Artificial Sequence
  Synthetic
uuacaggcgggguuuuucuu

SEQ ID NO: 140907 - RNA, 21 nt, Artificial Sequence
  Synthetic
guuacaggcgggguuuuucuu

SEQ ID NO: 140908 - RNA, 22 nt, Artificial Sequence
  Synthetic
uguuacaggcgggguuuuucuu

SEQ ID NO: 140909 - RNA, 23 nt, Artificial Sequence
  Synthetic
guguuacaggcgggguuuuucuu

SEQ ID NO: 140910 - RNA, 24 nt, Artificial Sequence
  Synthetic
cguguuacaggcgggguuuuucuu

SEQ ID NO: 140911 - RNA, 18 nt, Artificial Sequence
  Synthetic
cugcugguggcuccaguu

SEQ ID NO: 140912 - RNA, 19 nt, Artificial Sequence
  Synthetic
ccugcugguggcuccaguu

SEQ ID NO: 140913 - RNA, 20 nt, Artificial Sequence
  Synthetic
uccugcugguggcuccaguu

SEQ ID NO: 140914 - RNA, 21 nt, Artificial Sequence
  Synthetic
uuccugcugguggcuccaguu

SEQ ID NO: 140915 - RNA, 22 nt, Artificial Sequence
  Synthetic
uuuccugcugguggcuccaguu

SEQ ID NO: 140916 - RNA, 23 nt, Artificial Sequence
  Synthetic
uuuuccugcugguggcuccaguu

SEQ ID NO: 140917 - RNA, 24 nt, Artificial Sequence
  Synthetic
auuuuccugcugguggcuccaguu

SEQ ID NO: 140918 - RNA, 18 nt, Artificial Sequence
  Synthetic
gccauuuguucagugguu

SEQ ID NO: 140919 - RNA, 19 nt, Artificial Sequence
  Synthetic
ugccauuuguucagugguu

SEQ ID NO: 140920 - RNA, 20 nt, Artificial Sequence
  Synthetic
gugccauuuguucagugguu

SEQ ID NO: 140921 - RNA, 21 nt, Artificial Sequence
  Synthetic
agugccauuuguucagugguu

SEQ ID NO: 140922 - RNA, 22 nt, Artificial Sequence
  Synthetic
uagugccauuuguucagugguu

SEQ ID NO: 140923 - RNA, 23 nt, Artificial Sequence
  Synthetic
cuagugccauuuguucagugguu

SEQ ID NO: 140924 - RNA, 24 nt, Artificial Sequence
  Synthetic
acuagugccauuuguucagugguu

SEQ ID NO: 140925 - RNA, 18 nt, Artificial Sequence
  Synthetic
  misc_feature (5)..(5): n is a, c, g, or u
aaaanaucaaacacuguu

SEQ ID NO: 140926 - RNA, 19 nt, Artificial Sequence
  Synthetic
  misc_feature (6)..(6): n is a, c, g, or u
caaaanaucaaacacuguu

SEQ ID NO: 140927 - RNA, 20 nt, Artificial Sequence
  Synthetic
  misc_feature (7)..(7): n is a, c, g, or u
acaaaanaucaaacacuguu

SEQ ID NO: 140928 - RNA, 21 nt, Artificial Sequence
  Synthetic
  misc_feature (8)..(8): n is a, c, g, or u
uacaaaanaucaaacacuguu

SEQ ID NO: 140929 - RNA, 22 nt, Artificial Sequence
  Synthetic
  misc_feature (9)..(9): n is a, c, g, or u
guacaaaanaucaaacacuguu

SEQ ID NO: 140930 - RNA, 23 nt, Artificial Sequence
  Synthetic
  misc_feature (10)..(10): n is a, c, g, or u
uguacaaaanaucaaacacuguu

SEQ ID NO: 140931 - RNA, 24 nt, Artificial Sequence
  Synthetic
  misc_feature (11)..(11): n is a, c, g, or u
uuguacaaaanaucaaacacuguu

SEQ ID NO: 140932 - RNA, 18 nt, Artificial Sequence
  Synthetic
cuuccggaaacuacuguu

SEQ ID NO: 140933 - RNA, 19 nt, Artificial Sequence
  Synthetic
acuuccggaaacuacuguu

SEQ ID NO: 140934 - RNA, 20 nt, Artificial Sequence
  Synthetic
cacuuccggaaacuacuguu

SEQ ID NO: 140935 - RNA, 21 nt, Artificial Sequence
  Synthetic
acacuuccggaaacuacuguu

SEQ ID NO: 140936 - RNA, 22 nt, Artificial Sequence
  Synthetic
aacacuuccggaaacuacuguu

SEQ ID NO: 140937 - RNA, 23 nt, Artificial Sequence
  Synthetic
caacacuuccggaaacuacuguu

SEQ ID NO: 140938 - RNA, 24 nt, Artificial Sequence
  Synthetic
ucaacacuuccggaaacuacuguu

SEQ ID NO: 140939 - RNA, 18 nt, Artificial Sequence
  Synthetic
gggacgaaucuuucuguu

SEQ ID NO: 140940 - RNA, 19 nt, Artificial Sequence
  Synthetic
ggggacgaaucuuucuguu

SEQ ID NO: 140941 - RNA, 20 nt, Artificial Sequence
  Synthetic
uggggacgaaucuuucuguu

SEQ ID NO: 140942 - RNA, 21 nt, Artificial Sequence
  Synthetic
auggggacgaaucuuucuguu

SEQ ID NO: 140943 - RNA, 22 nt, Artificial Sequence
  Synthetic
cauggggacgaaucuuucuguu

SEQ ID NO: 140944 - RNA, 23 nt, Artificial Sequence
  Synthetic
gcauggggacgaaucuuucuguu

SEQ ID NO: 140945 - RNA, 24 nt, Artificial Sequence
  Synthetic
ggcauggggacgaaucuuucuguu

SEQ ID NO: 140946 - RNA, 18 nt, Artificial Sequence
  Synthetic
aggaccccugcucguguu

SEQ ID NO: 140947 - RNA, 19 nt, Artificial Sequence
  Synthetic
uaggaccccugcucguguu

SEQ ID NO: 140948 - RNA, 20 nt, Artificial Sequence
  Synthetic
cuaggaccccugcucguguu

SEQ ID NO: 140949 - RNA, 21 nt, Artificial Sequence
  Synthetic
ccuaggaccccugcucguguu

SEQ ID NO: 140950 - RNA, 22 nt, Artificial Sequence
  Synthetic
uccuaggaccccugcucguguu

SEQ ID NO: 140951 - RNA, 23 nt, Artificial Sequence
  Synthetic
uuccuaggaccccugcucguguu

SEQ ID NO: 140952 - RNA, 24 nt, Artificial Sequence
  Synthetic
auuccuaggaccccugcucguguu

SEQ ID NO: 140953 - RNA, 18 nt, Artificial Sequence
  Synthetic
ggcgggguuuuucuuguu

SEQ ID NO: 140954 - RNA, 19 nt, Artificial Sequence
  Synthetic
aggcgggguuuuucuuguu

SEQ ID NO: 140955 - RNA, 20 nt, Artificial Sequence
  Synthetic
caggcgggguuuuucuuguu

SEQ ID NO: 140956 - RNA, 21 nt, Artificial Sequence
  Synthetic
acaggcgggguuuuucuuguu

SEQ ID NO: 140957 - RNA, 22 nt, Artificial Sequence
  Synthetic
uacaggcgggguuuuucuuguu

SEQ ID NO: 140958 - RNA, 23 nt, Artificial Sequence
  Synthetic
uuacaggcgggguuuuucuuguu

SEQ ID NO: 140959 - RNA, 24 nt, Artificial Sequence
  Synthetic
guuacaggcgggguuuuucuuguu

SEQ ID NO: 140960 - RNA, 18 nt, Artificial Sequence
  Synthetic
  misc_feature (16)..(16): n is a, c, g, or u
ggguuauucccuaaanuu

SEQ ID NO: 140961 - RNA, 19 nt, Artificial Sequence
  Synthetic
  misc_feature (17)..(17): n is a, c, g, or u
gggguuauucccuaaanuu

SEQ ID NO: 140962 - RNA, 20 nt, Artificial Sequence
  Synthetic
  misc_feature (18)..(18): n is a, c, g, or u
ugggguuauucccuaaanuu

SEQ ID NO: 140963 - RNA, 21 nt, Artificial Sequence
  Synthetic
  misc_feature (19)..(19): n is a, c, g, or u
augggguuauucccuaaanuu

SEQ ID NO: 140964 - RNA, 22 nt, Artificial Sequence
  Synthetic
  misc_feature (20)..(20): n is a, c, g, or u
gaugggguuauucccuaaanuu

SEQ ID NO: 140965 - RNA, 23 nt, Artificial Sequence
  Synthetic
  misc_feature (21)..(21): n is a, c, g, or u
agaugggguuauucccuaaanuu

SEQ ID NO: 140966 - RNA, 24 nt, Artificial Sequence
  Synthetic
  misc_feature (1)..(1): n is a, c, g, or u
  misc_feature (22)..(22): n is a, c, g, or u
nagaugggguuauucccuaaanuu

SEQ ID NO: 140967 - RNA, 18 nt, Artificial Sequence
  Synthetic
  misc_feature (3)..(3): n is a, c, g, or u
  misc_feature (12)..(12): n is a, c, g, or u
  misc_feature (16)..(16): n is a, c, g, or u
ccnccacacggnggunuu

SEQ ID NO: 140968 - RNA, 19 nt, Artificial Sequence
  Synthetic
  misc_feature (1)..(1): n is a, c, g, or u
  misc_feature (4)..(4): n is a, c, g, or u
  misc_feature (13)..(13): n is a, c, g, or u
  misc_feature (17)..(17): n is a, c, g, or u
nccnccacacggnggunuu

SEQ ID NO: 140969 - RNA, 20 nt, Artificial Sequence
  Synthetic
  misc_feature (2)..(2): n is a, c, g, or u
  misc_feature (5)..(5): n is a, c, g, or u
  misc_feature (14)..(14): n is a, c, g, or u
  misc_feature (18)..(18): n is a, c, g, or u
cnccnccacacggnggunuu

SEQ ID NO: 140970 - RNA, 21 nt, Artificial Sequence
  Synthetic
  misc_feature (3)..(3): n is a, c, g, or u
  misc_feature (6)..(6): n is a, c, g, or u
  misc_feature (15)..(15): n is a, c, g, or u
  misc_feature (19)..(19): n is a, c, g, or u
acnccnccacacggnggunuu

SEQ ID NO: 140971 - RNA, 22 nt, Artificial Sequence
  Synthetic
  misc_feature (4)..(4): n is a, c, g, or u
  misc_feature (7)..(7): n is a, c, g, or u
  misc_feature (16)..(16): n is a, c, g, or u
  misc_feature (20)..(20): n is a, c, g, or u
cacnccnccacacggnggunuu

SEQ ID NO: 140972 - RNA, 23 nt, Artificial Sequence
  Synthetic
  misc_feature (5)..(5): n is a, c, g, or u
  misc_feature (8)..(8): n is a, c, g, or u
  misc_feature (17)..(17): n is a, c, g, or u
  misc_feature (21)..(21): n is a, c, g, or u
ucacnccnccacacggnggunuu

SEQ ID NO: 140973 - RNA, 24 nt, Artificial Sequence
  Synthetic
  misc_feature (1)..(1): n is a, c, g, or u
  misc_feature (6)..(6): n is a, c, g, or u
  misc_feature (9)..(9): n is a, c, g, or u
  misc_feature (18)..(18): n is a, c, g, or u
  misc_feature (22)..(22): n is a, c, g, or u
nucacnccnccacacggnggunuu

SEQ ID NO: 140974 - RNA, 18 nt, Artificial Sequence
  Synthetic
  misc_feature (12)..(12): n is a, c, g, or u
aauaggugucancaauuu

SEQ ID NO: 140975 - RNA, 19 nt, Artificial Sequence
  Synthetic
  misc_feature (13)..(13): n is a, c, g, or u
uaauaggugucancaauuu

SEQ ID NO: 140976 - RNA, 20 nt, Artificial Sequence
  Synthetic
  misc_feature (14)..(14): n is a, c, g, or u
uuaauaggugucancaauuu

SEQ ID NO: 140977 - RNA, 21 nt, Artificial Sequence
  Synthetic
  misc_feature (15)..(15): n is a, c, g, or u
auuaauaggugucancaauuu

SEQ ID NO: 140978 - RNA, 22 nt, Artificial Sequence
  Synthetic
  misc_feature (16)..(16): n is a, c, g, or u
uauuaauaggugucancaauuu

SEQ ID NO: 140979 - RNA, 23 nt, Artificial Sequence
  Synthetic
  misc_feature (17)..(17): n is a, c, g, or u
uuauuaauaggugucancaauuu

SEQ ID NO: 140980 - RNA, 24 nt, Artificial Sequence
  Synthetic
  misc_feature (18)..(18): n is a, c, g, or u
auuauuaauaggugucancaauuu

SEQ ID NO: 140981 - RNA, 18 nt, Artificial Sequence
  Synthetic
guggacuucucucaauuu

SEQ ID NO: 140982 - RNA, 19 nt, Artificial Sequence
  Synthetic
gguggacuucucucaauuu

SEQ ID NO: 140983 - RNA, 20 nt, Artificial Sequence
  Synthetic
ugguggacuucucucaauuu

SEQ ID NO: 140984 - RNA, 21 nt, Artificial Sequence
  Synthetic
gugguggacuucucucaauuu

SEQ ID NO: 140985 - RNA, 22 nt, Artificial Sequence
  Synthetic
cgugguggacuucucucaauuu

SEQ ID NO: 140986 - RNA, 23 nt, Artificial Sequence
  Synthetic
ucgugguggacuucucucaauuu

SEQ ID NO: 140987 - RNA, 24 nt, Artificial Sequence
  Synthetic
cucgugguggacuucucucaauuu

SEQ ID NO: 140988 - RNA, 18 nt, Artificial Sequence
  Synthetic
cuggguggguaauaauuu

SEQ ID NO: 140989 - RNA, 19 nt, Artificial Sequence
  Synthetic
ccuggguggguaauaauuu

SEQ ID NO: 140990 - RNA, 20 nt, Artificial Sequence
  Synthetic
accuggguggguaauaauuu

SEQ ID NO: 140991 - RNA, 21 nt, Artificial Sequence
  Synthetic
uaccuggguggguaauaauuu

SEQ ID NO: 140992 - RNA, 22 nt, Artificial Sequence
  Synthetic
cuaccuggguggguaauaauuu

SEQ ID NO: 140993 - RNA, 23 nt, Artificial Sequence
  Synthetic
gcuaccuggguggguaauaauuu

SEQ ID NO: 140994 - RNA, 24 nt, Artificial Sequence
  Synthetic
agcuaccuggguggguaauaauuu

SEQ ID NO: 140995 - RNA, 18 nt, Artificial Sequence
  Synthetic
  misc_feature (12)..(12): n is a, c, g, or u
acacguagcgcnucauuu

SEQ ID NO: 140996 - RNA, 19 nt, Artificial Sequence
  Synthetic
  misc_feature (1)..(1): n is a, c, g, or u
  misc_feature (13)..(13): n is a, c, g, or u
nacacguagcgcnucauuu

SEQ ID NO: 140997 - RNA, 20 nt, Artificial Sequence
  Synthetic
  misc_feature (2)..(2): n is a, c, g, or u
  misc_feature (14)..(14): n is a, c, g, or u
cnacacguagcgcnucauuu

SEQ ID NO: 140998 - RNA, 21 nt, Artificial Sequence
  Synthetic
  misc_feature (3)..(3): n is a, c, g, or u
  misc_feature (15)..(15): n is a, c, g, or u
acnacacguagcgcnucauuu

SEQ ID NO: 140999 - RNA, 22 nt, Artificial Sequence
  Synthetic
  misc_feature (4)..(4): n is a, c, g, or u
  misc_feature (16)..(16): n is a, c, g, or u
aacnacacguagcgcnucauuu

SEQ ID NO: 141000 - RNA, 23 nt, Artificial Sequence
  Synthetic
  misc_feature (5)..(5): n is a, c, g, or u
  misc_feature (17)..(17): n is a, c, g, or u
aaacnacacguagcgcnucauuu

SEQ ID NO: 141001 - RNA, 24 nt, Artificial Sequence
  Synthetic
  misc_feature (6)..(6): n is a, c, g, or u
  misc_feature (18)..(18): n is a, c, g, or u
gaaacnacacguagcgcnucauuu

SEQ ID NO: 141002 - RNA, 18 nt, Artificial Sequence
  Synthetic
  misc_feature (4)..(4): n is a, c, g, or u
uaunucuugccuuacuuu

SEQ ID NO: 141003 - RNA, 19 nt, Artificial Sequence
  Synthetic
  misc_feature (5)..(5): n is a, c, g, or u
auaunucuugccuuacuuu

SEQ ID NO: 141004 - RNA, 20 nt, Artificial Sequence
  Synthetic
  misc_feature (6)..(6): n is a, c, g, or u
cauaunucuugccuuacuuu

SEQ ID NO: 141005 - RNA, 21 nt, Artificial Sequence
  Synthetic
  misc_feature (7)..(7): n is a, c, g, or u
ucauaunucuugccuuacuuu

SEQ ID NO: 141006 - RNA, 22 nt, Artificial Sequence
  Synthetic
  misc_feature (8)..(8): n is a, c, g, or u
uucauaunucuugccuuacuuu

SEQ ID NO: 141007 - RNA, 23 nt, Artificial Sequence
  Synthetic
  misc_feature (9)..(9): n is a, c, g, or u
uuucauaunucuugccuuacuuu

SEQ ID NO: 141008 - RNA, 24 nt, Artificial Sequence
  Synthetic
  misc_feature (10)..(10): n is a, c, g, or u
guuucauaunucuugccuuacuuu

SEQ ID NO: 141009 - RNA, 18 nt, Artificial Sequence
  Synthetic
  misc_feature (7)..(7): n is a, c, g, or u
  misc_feature (10)..(10): n is a, c, g, or u
cccaucnucnugggcuuu

SEQ ID NO: 141010 - RNA, 19 nt, Artificial Sequence
  Synthetic
  misc_feature (8)..(8): n is a, c, g, or u
  misc_feature (11)..(11): n is a, c, g, or u
ucccaucnucnugggcuuu

SEQ ID NO: 141011 - RNA, 20 nt, Artificial Sequence
  Synthetic
  misc_feature (9)..(9): n is a, c, g, or u
  misc_feature (12)..(12): n is a, c, g, or u
aucccaucnucnugggcuuu

SEQ ID NO: 141012 - RNA, 21 nt, Artificial Sequence
  Synthetic
  misc_feature (10)..(10): n is a, c, g, or u
  misc_feature (13)..(13): n is a, c, g, or u
caucccaucnucnugggcuuu

SEQ ID NO: 141013 - RNA, 22 nt, Artificial Sequence
  Synthetic
  misc_feature (11)..(11): n is a, c, g, or u
  misc_feature (14)..(14): n is a, c, g, or u
ccaucccaucnucnugggcuuu

SEQ ID NO: 141014 - RNA, 23 nt, Artificial Sequence
  Synthetic
  misc_feature (12)..(12): n is a, c, g, or u
  misc_feature (15)..(15): n is a, c, g, or u
cccaucccaucnucnugggcuuu

SEQ ID NO: 141015 - RNA, 24 nt, Artificial Sequence
  Synthetic
  misc_feature (13)..(13): n is a, c, g, or u
  misc_feature (16)..(16): n is a, c, g, or u
ucccaucccaucnucnugggcuuu

SEQ ID NO: 141016 - RNA, 18 nt, Artificial Sequence
  Synthetic
auuauuuacauacucuuu

SEQ ID NO: 141017 - RNA, 19 nt, Artificial Sequence
  Synthetic
cauuauuuacauacucuuu

SEQ ID NO: 141018 - RNA, 20 nt, Artificial Sequence
  Synthetic
acauuauuuacauacucuuu

SEQ ID NO: 141019 - RNA, 21 nt, Artificial Sequence
  Synthetic
gacauuauuuacauacucuuu

SEQ ID NO: 141020 - RNA, 22 nt, Artificial Sequence
  Synthetic
  misc_feature (1)..(1): n is a, c, g, or u
ngacauuauuuacauacucuuu

SEQ ID NO: 141021 - RNA, 23 nt, Artificial Sequence
  Synthetic
  misc_feature (2)..(2): n is a, c, g, or u
cngacauuauuuacauacucuuu

SEQ ID NO: 141022 - RNA, 24 nt, Artificial Sequence
  Synthetic
  misc_feature (3)..(3): n is a, c, g, or u
ccngacauuauuuacauacucuuu

SEQ ID NO: 141023 - RNA, 18 nt, Artificial Sequence
  Synthetic
  misc_feature (4)..(4): n is a, c, g, or u
aaanaucaaacacuguuu

SEQ ID NO: 141024 - RNA, 19 nt, Artificial Sequence
  Synthetic
  misc_feature (5)..(5): n is a, c, g, or u
aaaanaucaaacacuguuu

SEQ ID NO: 141025 - RNA, 20 nt, Artificial Sequence
  Synthetic
  misc_feature (6)..(6): n is a, c, g, or u
caaaanaucaaacacuguuu

SEQ ID NO: 141026 - RNA, 21 nt, Artificial Sequence
  Synthetic
  misc_feature (7)..(7): n is a, c, g, or u
acaaaanaucaaacacuguuu

SEQ ID NO: 141027 - RNA, 22 nt, Artificial Sequence
  Synthetic
  misc_feature (8)..(8): n is a, c, g, or u
uacaaaanaucaaacacuguuu

SEQ ID NO: 141028 - RNA, 23 nt, Artificial Sequence
  Synthetic
  misc_feature (9)..(9): n is a, c, g, or u
guacaaaanaucaaacacuguuu

SEQ ID NO: 141029 - RNA, 24 nt, Artificial Sequence
  Synthetic
  misc_feature (10)..(10): n is a, c, g, or u
uguacaaaanaucaaacacuguuu

SEQ ID NO: 141030 - RNA, 18 nt, Artificial Sequence
  Synthetic
ggucugugccaaguguuu

SEQ ID NO: 141031 - RNA, 19 nt, Artificial Sequence
  Synthetic
uggucugugccaaguguuu

SEQ ID NO: 141032 - RNA, 20 nt, Artificial Sequence
  Synthetic
cuggucugugccaaguguuu

SEQ ID NO: 141033 - RNA, 21 nt, Artificial Sequence
  Synthetic
ccuggucugugccaaguguuu

SEQ ID NO: 141034 - RNA, 22 nt, Artificial Sequence
  Synthetic
gccuggucugugccaaguguuu

SEQ ID NO: 141035 - RNA, 23 nt, Artificial Sequence
  Synthetic
ggccuggucugugccaaguguuu

SEQ ID NO: 141036 - RNA, 24 nt, Artificial Sequence
  Synthetic
cggccuggucugugccaaguguuu

SEQ ID NO: 141037 - RNA, 18 nt, Artificial Sequence
  Synthetic
uucaaagacuguguguuu

SEQ ID NO: 141038 - RNA, 19 nt, Artificial Sequence
  Synthetic
cuucaaagacuguguguuu

SEQ ID NO: 141039 - RNA, 20 nt, Artificial Sequence
  Synthetic
acuucaaagacuguguguuu

SEQ ID NO: 141040 - RNA, 21 nt, Artificial Sequence
  Synthetic
uacuucaaagacuguguguuu

SEQ ID NO: 141041 - RNA, 22 nt, Artificial Sequence
  Synthetic
cuacuucaaagacuguguguuu

SEQ ID NO: 141042 - RNA, 23 nt, Artificial Sequence
  Synthetic
ccuacuucaaagacuguguguuu

SEQ ID NO: 141043 - RNA, 24 nt, Artificial Sequence
  Synthetic
gccuacuucaaagacuguguguuu

SEQ ID NO: 141044 - RNA, 18 nt, Artificial Sequence
  Synthetic
  misc_feature (15)..(15): n is a, c, g, or u
uggcaaacuccuucnuuu

SEQ ID NO: 141045 - RNA, 19 nt, Artificial Sequence
  Synthetic
  misc_feature (16)..(16): n is a, c, g, or u
auggcaaacuccuucnuuu

SEQ ID NO: 141046 - RNA, 20 nt, Artificial Sequence
  Synthetic
  misc_feature (17)..(17): n is a, c, g, or u
aauggcaaacuccuucnuuu

SEQ ID NO: 141047 - RNA, 21 nt, Artificial Sequence
  Synthetic
  misc_feature (18)..(18): n is a, c, g, or u
gaauggcaaacuccuucnuuu

SEQ ID NO: 141048 - RNA, 22 nt, Artificial Sequence
  Synthetic
  misc_feature (19)..(19): n is a, c, g, or u
ugaauggcaaacuccuucnuuu

SEQ ID NO: 141049 - RNA, 23 nt, Artificial Sequence
  Synthetic
  misc_feature (20)..(20): n is a, c, g, or u
cugaauggcaaacuccuucnuuu

SEQ ID NO: 141050 - RNA, 24 nt, Artificial Sequence
  Synthetic
  misc_feature (21)..(21): n is a, c, g, or u
ccugaauggcaaacuccuucnuuu

SEQ ID NO: 141051 - RNA, 18 nt, Artificial Sequence
  Synthetic
uggacuucucucaauuuu

SEQ ID NO: 141052 - RNA, 19 nt, Artificial Sequence
  Synthetic
guggacuucucucaauuuu

SEQ ID NO: 141053 - RNA, 20 nt, Artificial Sequence
  Synthetic
gguggacuucucucaauuuu

SEQ ID NO: 141054 - RNA, 21 nt, Artificial Sequence
  Synthetic
ugguggacuucucucaauuuu

SEQ ID NO: 141055 - RNA, 22 nt, Artificial Sequence
  Synthetic
gugguggacuucucucaauuuu

SEQ ID NO: 141056 - RNA, 23 nt, Artificial Sequence
  Synthetic
cgugguggacuucucucaauuuu

SEQ ID NO: 141057 - RNA, 24 nt, Artificial Sequence
  Synthetic
ucgugguggacuucucucaauuuu

SEQ ID NO: 141058 - RNA, 18 nt, Artificial Sequence
  Synthetic
  misc_feature (3)..(3): n is a, c, g, or u
aunucuugccuuacuuuu

SEQ ID NO: 141059 - RNA, 19 nt, Artificial Sequence
  Synthetic
  misc_feature (4)..(4): n is a, c, g, or u
uaunucuugccuuacuuuu

SEQ ID NO: 141060 - RNA, 20 nt, Artificial Sequence
  Synthetic
  misc_feature (5)..(5): n is a, c, g, or u
auaunucuugccuuacuuuu

SEQ ID NO: 141061 - RNA, 21 nt, Artificial Sequence
  Synthetic
  misc_feature (6)..(6): n is a, c, g, or u
cauaunucuugccuuacuuuu

SEQ ID NO: 141062 - RNA, 22 nt, Artificial Sequence
  Synthetic
  misc_feature (7)..(7): n is a, c, g, or u
ucauaunucuugccuuacuuuu

SEQ ID NO: 141063 - RNA, 23 nt, Artificial Sequence
  Synthetic
  misc_feature (8)..(8): n is a, c, g, or u
uucauaunucuugccuuacuuuu

SEQ ID NO: 141064 - RNA, 24 nt, Artificial Sequence
  Synthetic
  misc_feature (9)..(9): n is a, c, g, or u
uuucauaunucuugccuuacuuuu

SEQ ID NO: 141065 - RNA, 18 nt, Artificial Sequence
  Synthetic
  misc_feature (3)..(3): n is a, c, g, or u
aanaucaaacacuguuuu

SEQ ID NO: 141066 - RNA, 19 nt, Artificial Sequence
  Synthetic
  misc_feature (4)..(4): n is a, c, g, or u
aaanaucaaacacuguuuu

SEQ ID NO: 141067 - RNA, 20 nt, Artificial Sequence
  Synthetic
  misc_feature (5)..(5): n is a, c, g, or u
aaaanaucaaacacuguuuu

SEQ ID NO: 141068 - RNA, 21 nt, Artificial Sequence
  Synthetic
  misc_feature (6)..(6): n is a, c, g, or u
caaaanaucaaacacuguuuu

SEQ ID NO: 141069 - RNA, 22 nt, Artificial Sequence
  Synthetic
  misc_feature (7)..(7): n is a, c, g, or u
acaaaanaucaaacacuguuuu

SEQ ID NO: 141070 - RNA, 23 nt, Artificial Sequence
  Synthetic
  misc_feature (8)..(8): n is a, c, g, or u
uacaaaanaucaaacacuguuuu

SEQ ID NO: 141071 - RNA, 24 nt, Artificial Sequence
  Synthetic
  misc_feature (9)..(9): n is a, c, g, or u
guacaaaanaucaaacacuguuuu

SEQ ID NO: 141072 - DNA, 8 bp, Artificial Sequence
  Synthetic
  misc_feature (1)..(4): n is a, c, g, or t
nnnngatt

SEQ ID NO: 141073 - DNA, 7 bp, Artificial Sequence
  Synthetic
  misc_feature (1)..(3): n is a, c, g, or t
nnngctt
